United States Patent Application Publication US 2022/0127612 A1 - sequence listing, part 2

SEQ ID NO: 8170 - protein, 150 aa, Homo sapiens
MEEPEEPADSGQSLVPVYIYSPEIVKPKVASMEEMATFHTDAYLQHLQKVSQEGDDDHPDSIEYGLGYDCPATEGIFDYAAAIGGATITAAQCLIDGMCKVAINWSGGWHHAKKDEASGFCYLNDAVLGILRLRRKFERILYVDLDLHHG

SEQ ID NO: 8171 - protein, 231 aa, Homo sapiens
MPRTKQIHPRNLRDKIEEAQKELNGAEVSKKEILQAGVKGTSESLKGNLTKHMKSKAHSKKCVDLGVSVGLIDEQDTEESDEKQRFSYERSGYDLEESDGPDEDDNENEDDDEDSQAESVLSATPSVTASPQHLPSRSSLQDPVSTDEDVRITDCFSGVHTDPMDVLPRALLTRMTVLSTAQSDYNRKTLSPGKARQRAARDENDTIPSVDTSRSPCHQMSVDYPESEEIL

SEQ ID NO: 8172 - protein, 130 aa, Homo sapiens
MGQICQRESATAAEKPKLHLLAESEIDKYLYAMRLSDETLIDIMTRFRKEMKNGLSRDFNPTATVKMLPTFVRSIPDGSEKGDFIALDLGGSSFRILRVQVNHEKNQNVHMESEVYDTPENIVHGSGSQL

SEQ ID NO: 8173 - protein, 921 aa, Homo sapiens
MGQICQRESATAAEKPKLHLLAESEIDKYLYAMRLSDETLIDIMTRFRKEMKNGLSRDFNPTATVKMLPTFVRSIPDGSEKGDFIALDLGGSSFRILRVQVNHEKNQNVHMESEVYDTPENIVHGSGSQLFDHVAECLGDFMEKRKIKDKKLPVGFTFSFPCQQSKIDEAILITWTKRFKASGVEGADVVKLLNKAIKKRGDYDANIVAVVNDTVGTMMTCGYDDQHCEVGLIIGTGTNACYMEELRHIDLVEGDEGRMCINTEWGAFGDDGSLEDIRTEFDREIDRGSLNPGKQLFEKMVSGMYLGELVRLILVKMAKEGLLFEGRITPELLTRGKFNTSDVSAIEKNKEGLHNAKEILTRLGVEPSDDDCVSVQHVCTIVSFRSANLVAATLGAILNRLRDNKGTPRLRTTVGVDGSLYKTHPQYSRRFHKTLRRLVPDSDVRFLLSESGSGKGAAMVTAVAYRLAEQHRQIEETLAHFHLTKDMLLEVKKRMRAEMELGLRKQTHNNAVVKMLPSFVRRTPDGTENGDFLALDLGGTNFRVLLVKIRSGKKRTVEMHNKIYAIPIEIMQGTGEELFDHIVSCISDFLDYMGIKGPRMPLGFTFSFPCQQTSLDAGILITWTKGFKATDCVGHDVVTLLRDAIKRREEFDLDVVAVVNDTVGTMMTCAYEEPTCEVGLIVGTGSNACYMEEMKNVEMVEGDQGQMCINMEWGAFGDNGCLDDIRTHYDRLVDEYSLNAGKQRYEKMISGMYLGEIVRNILIDFTKKGFLFRGQISETLKTRGIFETKFLSQIESDRLALLQVRAILQQLGLNSTCDDSILVKTVCGVVSRRAAQLCGAGMAAVVDKIRENRGLDRLNVTVGVDGTLYKLHPHFSRIMHQTVKELSPKCNVSFLLSEDGSGKGAALITAVGVRLRTEASS

SEQ ID NO: 8174 - protein, 171 aa, Homo sapiens
MALLFLLPLVMQGVSRAEMGTADLGPSSVPTPTNVTIESYNMNPIVYWEYQIMPQVPVFTVEVKNYGVKNSEWIDACINISHHYCNISDHVGDPSNSLWVRVKARVGQKESAYAKSEEFAVCRDGKIGPPKLDIRKEEKQIMIDIFHPSVFVNGDEQEVDYDPETTCYIRV

SEQ ID NO: 8175 - protein, 162 aa, Homo sapiens
MFSGGCHSPGFGRPSPAFPAPGSPPPAPRPCRQETGEQIAIKQCRQELSPRNRERWCLEIQIMRRLTHPNVVAARDVPEGMQNLAPNDLPLLAMEYCQGGDLRKYLNQFENCCGLREGAILTLLSDIGKSQSRNSGRVLQGECGAPPLRLDTFMKTESSIGI

SEQ ID NO: 8176 - protein, 754 aa, Homo sapiens
MFSGGCHSPGFGRPSPAFPAPGSPPPAPRPCRQETGEQIAIKQCRQELSPRNRERWCLEIQIMRRLTHPNVVAARDVPEGMQNLAPNDLPLLAMEYCQGGDLRKYLNQFENCCGLREGAILTLLSDIASALRYLHENRIIHRDLKPENIVLQQGEQRLIHKIIDLGYAKELDQGSLCTSFVGTLQYLAPELLEQQKYTVTVDYWSFGTLAFECITGFRPFLPNWQPVQWHSKVRQKSEVDIVVSEDLNGTVKFSSSLPYPNNLNSVLAERLEKWLQLMLMWHPRQRGTDPTYGPNGCFKALDDILNLKLVHILNMVTGTIHTYPVTEDESLQSLKARIQQDTGIPEEDQELLQEAGLALIPDKPATQCISDGKLNEGHTLDMDLVFLFDNSKITYETQISPRPQPESVSCILQEPKRNLAFFQLRKVWGQVWHSIQTLKEDCNRLQQGQRAAMMNLLRNNSCLSKMKNSMASMSQQLKAKLDFFKTSIQIDLEKYSEQTEFGITSDKLLLAWREMEQAVELCGRENEVKLLVERMMALQTDIVDLQRSPMGRKQGGTLDDLEEQARELYRRLREKPRDQRTEGDSQEMVRLLLQAIQSFEKKVRVIYTQLSKTVVCKQKALELLPKVEEVVSLMNEDEKTVVRLQEKRQKELWNLLKIACSKVRGPVSGSPDSMNASRLSQPGQLMSQPSTASNSLPEPAKKSEELVAEAHNLCTLLENAIQDTVREQDQSFTALDWSWLQTEEEEHSCLEQAS

SEQ ID NO: 8177 - protein, 754 aa, Homo sapiens; identical to SEQ ID NO: 8176

SEQ ID NO: 8178 - protein, 560 aa, Homo sapiens
MFSGGCHSPGFGRPSPAFPAPGSPPPAPRPCRQETGEQIAIKQCRQELSPRNRERWCLEIQIMRRLTHPNVVAARDVPEGMQNLAPNDLPLLAMEYCQGGDLRKYLNQFENCCGLREGAILTLLSDIASALRYLHENRIIHRDLKPENIVLQQGEQRLIHKIIDLGYAKELDQGSLCTSFVGTLQYLAPELLEQQKYTVTVDYWSFGTLAFECITGFRPFLPNWQPVQWHSKVRQKSEVDIVVSEDLNGTVKFSSSLPYPNNLNSVLAERLEKWLQLMLMWHPRQRGTDPTYGPNGCFKALDDILNLKLVHILNMVTGTIHTYPVTEDESLQSLKARIQQDTGIPEEDQELLQEAGLALIPDKPATQCISDGKLNEGHTLDMDLVFLFDNSKITYETQISPRPQPESVSCILQEPKRNLAFFQLRKVWGQVWHSIQTLKEDCNRLQQGQRAAMMNLLRNNSCLSKMKNSMASMSQQLKAKLDFFKTSIQIDLEKYSEQTEFGIRERSETPGRTDDGSADRHCGLTEEPHGPEAGGNAGRPRGASKGAVQETKGKTSRPAN

SEQ ID NO: 8179 - protein, 167 aa, Homo sapiens
MAAAGAFRLRRAASALLLRSPRLPARELSAPARLYHKKVVDHYENPRNVGSLDKTSKNVGTGLVGAPACGDVMKLQIQVDEKGKIVDARFKTFGCGSAIASSSLATEWVKGKTVEEALTIKNTDIAKELCLPPVKLHCSMLAEDAIKAALADYKLKQEPKKGEAEKK

SEQ ID NO: 8180 - protein, 96 aa, Homo sapiens
MAAVQAAEVKVDGSEPKLSKNELKRRLKAEKKVAEKEAKQKELSEKQLSQATAAATNHTTDNGVGPEEESVDPNVGSMPKELLGESSSSMIFEERG

SEQ ID NO: 8181 - protein, 597 aa, Homo sapiens
MAAVQAAEVKVDGSEPKLSKNELKRRLKAEKKVAEKEAKQKELSEKQLSQATAAATNHTTDNGVGPEEESVDPNQYYKIRSQAIHQLKVNGEDPYPHKFHVDISLTDFIQKYSHLQPGDHLTDITLKVAGRIHAKRASGGKLIFYDLRGEGVKLQVMANSRNYKSEEEFIHINNKLRRGDIIGVQGNPGKTKKGELSIIPYEITLLSPCLHMLPHLHFGLKDKETRYRQRYLDLILNDFVRQKFIIRSKIITYIRSFLDELGFLEIETPMMNIIPGGAVAKPFITYHNELDMNLYMRIAPELYHKMLVVGGIDRVYEIGRQFRNEGIDLTHNPEFTTCEFYMAYADYHDLMEITEKMVSGMVKHITGSYKVTYHPDGPEGQAYDVDFTPPFRRINMVEELEKALGMKLPETNLFETEETRKILDDICVAKAVECPPPRTTARLLDKLVGEFLEVTCINPTFICDHPQIMSPLAKWHRSKEGLTERFELFVMKKEICNAYTELNDPMRQRQLFEEQAKAKAAGDDEAMFIDENFCTALEYGLPPTAGWGMGIDRVAMFLTDSNNIKEVLLFPAMKPEDKKENVATTDTLESTTVGTSV

SEQ ID NO: 8182 - protein, 1072 aa, Homo sapiens
MAPPTGVLSSLLLLVTIAGCARKQCSEGRTYSNAVISPNLETTRIMRVSHTFPVVDCTAACCDLSSCDLAWWFEGRCYLVSCPHKENCEPKKMGPIRSYLTFVLRPVQRPAQLLDYGDMMLNRGSPSGIWGDSPEDIRKDLTFLGKDWGLEEMSEYSDDYRELEKDLLQPSGKQEPRGSAEYTDWGLLPGSEGAFNSSVGDSPAVPAETQQDPELHYLNESASTPAPKLPERSVLLPLPTTPSSGEVLEKEKASQLQEQSSNSSGKEVLMPSHSLPPASLELSSVTVEKSPVLTVTPGSTEHSIPTPPTSAAPSESTPSELPISPTTAPRTVKELTVSAGDNLIITLPDNEVELKAFVAPAPPVETTYNYEWNLISHPTDYQGEIKQGHKQTLNLSQLSVGLYVFKVTVSSENAFGEGFVNVTVKPARRVNLPPVAVVSPQLQELTLPLTSALIDGSQSTDDTEIVSYHWEEINGPFIEEKTSVDSPVLRLSNLDPGNYSFRLTVTDSDGATNSTTAALIVNNAVDYPPVANAGPNHTITLPQNSITLNGNQSSDDHQIVLYEWSLGPGSEGKHVVMQGVQTPYLHLSAMQEGDYTFQLKVTDSSRQQSTAVVTVIVQPENNRPPVAVAGPDKELIFPVESATLDGSSSSDDHGIVFYHWEHVRGPSAVEMENIDKAIATVTGLQVGTYHFRLTVKDQQGLSSTSTLTVAVKKENNSPPRARAGGRHVLVLPNNSITLDGSRSTDDQRIVSYLWIRDGQSPAAGDVIDGSDHSVALQLTNLVEGVYTFHLRVTDSQGASDTDTATVEVQPDPRKSGLVELTLQVGVGQLTEQRKDTLVRQLAVLLNVLDSDIKVQKIRAHSDLSTVIVFYVQSRPPFKVLKAAEVARNLHMRLSKEKADFLLFKVLRVDTAGCLLKCSGHGHCDPLTKRCICSHLWMENLIQRYIWDGESNCEWSIFYVTVLAFTLIVLTGGFTWLCICCCKRQKRTKIRKKTKYTILDNMDEQERMELRPKYGIKHRSTEHNSSLMVSESEFDSDQDTIFSREKMERGNPKVSMNGSIRNGASFSYCSKDR

SEQ ID NO: 8183 - protein, 1461 aa, Homo sapiens
MFWDFSKDVAVQVLPLDKIEENNKQKANDIFISQYTMGQKDALRTVLKQKAQSMPVFKEVKVHLLEDAGIEKDAVTQETRISPSGIDSATTVAAATAAAIATAAPLIKVQSDLEAKVNSVTELLSKLQETDKHLQRVTEQQTSIQRKQEKLHCHDHEKQMNVFMEQHIRHLEKLQQQQIDIQTHFISAALKTSSFQPVSMPSSRAVEKYSVKPEHPNLGSCNPSLYNTFASKQAPLKEVEDTSFDKQKSPLETPAPRRFAPVPVSRDDELSKRENLLEEKENMEVSCHRGNVRLLEQILNNNDSLTRKSESSNTTSLTRSKIGWTPEKTNRFPSCEELETTKVTMQKSDDVLHDLGQKEKETNSMVQPKESLSMLKLPDLPQNSVKLQTTNTTRSVLKDAEKILRGVQNNKKVLEENLEAIIRAKDGAAMYSLINALSTNREMSEKIRIRKTVDEWIKTISAEIQDELSRTDYEQKRFDQKNQRTKKGQNMTKDIRTNTQDKTVNKSVIPRKHSQKQIEEHFRNLPMRGMPASSLQKERKEGLLKATTVIQDEDYMLQVYGKPVYQGHRSTLKKGPYLRFNSPSPKSRPQRPKVIERVKGTKVKSIRTQTDFYATKPKKMDSKMKHSVPVLPHGDQQYLFSPSREMPTFSGTLEGHLIPMAILLGQTQSNSDTMPPAGVIVSKPHPVTVTTSIPPSSRKVETGVKKPNIAIVEMKSEKKDPPQLTVQVLPSVDIDSISNSSADVLSPLSSPKEASLPPVQTWIKTPEIMKVDEEEVKFPGTNFDEIIDVIQEEEKCDEIPDSEPILEFNRSVKADSTKYNGPPFPPVASTFQPTADILDKVIERKETLENSLIQWVEQEIMSRIISGLFPVQQQIAPSISVSVSETSEPLTSDIVEGTSSGALQLFVDAGVPVNSNVIKHFVNEALAETIAVMLGDREAKKQGPVATGVSGDASTNETYLPARVCTPLPTPQPTPPCSPSSPAKECVLVKTPDSSPCDSDHDMAFPVKEICAEKGDDMPAIMLVNTPTVTPTTTPPPAAAVFTPTLSDISIDKLKVSSPELPKPWGDGDLPLEEENPNSPQEELHPRAIVMSVAKDEEPESMDFPAQPPPPEPVPFMPFPAGTKAPSPSQMPGSDSSTLESTLSVTVTETETLDKPISEGEILFSCGQKLAPKILEDIGLYLTNLNDSLSSTLHDAVEMEDDPPSEGQVIRMSHKKFHADAILSFAKQNQESAVSQQAVYHSEDLENSVGELSEGQRPQLTAAAENILMGHSLYMQPPVTNTQSLDQQCDPKPLSRQFDTVSGSIYEDSCASHGPMSLGELELEPNSKLVLPTTLLTAQENDVNLPVAAEDFSQYQLKQNQDVKQVEHKPSQSYLRVRNKSDIAPSQQQVSPGDMDRTQIELNPYLTCVFSGGKAVPLSASQMPPAKMSVMLPSVNLEDCSQSLSLSTMQEDMESSGADTF

SEQ ID NO: 8184 - protein, 1502 aa, Homo sapiens
MFWDFSKDVAVQVLPLDKIEENNKQKANDIFISQYTMGQKDALRTVLKQNVSLCLTGWSDHSGVITTHCSLYLLRLMRSSHLSLPSSWDYRAQSMPVFKEVKVHLLEDAGIEKDAVTQETRISPSGIDSATTVAAATAAAIATAAPLIKVQSDLEAKVNSVTELLSKLQETDKHLQRVTEQQTSIQRKQEKLHCHDHEKQMNVFMEQHIRHLEKLQQQQIDIQTHFISAALKTSSFQPVSMPSSRAVEKYSVKPEHPNLGSCNPSLYNTFASKQAPLKEVEDTSFDKQKSPLETPAPRRFAPVPVSRDDELSKRENLLEEKENMEVSCHRGNVRLLEQILNNNDSLTRKSESSNTTSLTRSKIGWTPEKTNRFPSCEELETTKVTMQKSDDVLHDLGQKEKETNSMVQPKESLSMLKLPDLPQNSVKLQTTNTTRSVLKDAEKILRGVQNNKKVLEENLEAIIRAKDGAAMYSLINALSTNREMSEKIRIRKTVDEWIKTISAEIQDELSRTDYEQKRFDQKNQRTKKGQNMTKDIRTNTQDKTVNKSVIPRKHSQKQIEEHFRNLPMRGMPASSLQKERKEGLLKATTVIQDEDYMLQVYGKPVYQGHRSTLKKGPYLRFNSPSPKSRPQRPKVIERVKGTKVKSIRTQTDFYATKPKKMDSKMKHSVPVLPHGDQQYLFSPSREMPTFSGTLEGHLIPMAILLGQTQSNSDTMPPAGVIVSKPHPVTVTTSIPPSSRKVETGVKKPNIAIVEMKSEKKDPPQLTVQVLPSVDIDSISNSSADVLSPLSSPKEASLPPVQTWIKTPEIMKVDEEEVKFPGTNFDEIIDVIQEEEKCDEIPDSEPILEFNRSVKADSTKYNGPPFPPVASTFQPTADILDKVIERKETLENSLIQWVEQEIMSRIISGLFPVQQQIAPSISVSVSETSEPLTSDIVEGTSSGALQLFVDAGVPVNSNVIKHFVNEALAETIAVMLGDREAKKQGPVATGVSGDASTNETYLPARVCTPLPTPQPTPPCSPSSPAKECVLVKTPDSSPCDSDHDMAFPVKEICAEKGDDMPAIMLVNTPTVTPTTTPPPAAAVFTPTLSDISIDKLKVSSPELPKPWGDGDLPLEEENPNSPQEELHPRAIVMSVAKDEEPESMDFPAQPPPPEPVPFMPFPAGTKAPSPSQMPGSDSSTLESTLSVTVTETETLDKPISEGEILFSCGQKLAPKILEDIGLYLTNLNDSLSSTLHDAVEMEDDPPSEGQVIRMSHKKFHADAILSFAKQNQESAVSQQAVYHSEDLENSVGELSEGQRPQLTAAAENILMGHSLYMQPPVTNTQSLDQQCDPKPLSRQFDTVSGSIYEDSCASHGPMSLGELELEPNSKLVLPTTLLTAQENDVNLPVAAEDFSQYQLKQNQDVKQVEHKPSQSYLRVRNKSDIAPSQQQVSPGDMDRTQIELNPYLTCVFSGGKAVPLSASQMPPAKMSVMLPSVNLEDCSQSLSLSTMQEDMESSGADTF

SEQ ID NO: 8185 - protein, 624 aa, Homo sapiens
MVGRSPSATPAERPPRGCAELAQRQQHEPDPRIGRAPVESRLLREAGPTPARAAGQLEYETQIKKMLCSKDSLGLKEELTDEDREKVAVHEGINSGTAMSRGLYQPATIFMGRQMSAILSMRDFSTEHKSPQPTKNFSIPDPHSHRQTAQSSNVTDSCVVQTSNDTQCLNKSDNIDGKASLQIGEKMPVTASVLSEEEQTHCLEIGSNTRHGKSNLSEGKKSAELNSPLRERLSPENRTTDLKCDSSSGSEGEILTREHIEVEEKRASPPVSPIPVSEYCESENKWSQEKHSPWEGVSDHLAHREPKSQKPFRKMQEEEEESWSTSSDLTISISEDDLILESPEPQPNPGGKMEGEDGIEALKLIHAEQERVALSTEKNCILQTLSSPDSEKESSTNAPTREPGQTPDSDVPRAQVGQHVATLKEHDNSVKEEATALLRKALTEECGRRSAIHSSESSCSLPSILNDNSGIKEAKPAVWLNSVPTREQEVSSGCGDKSKKENVAADIPITETEAYQLLKKATLQDNTNQTENRFQKTDASVSHLSGLNIGSGAFETKTANKIASEASFSSSEGSPLSRHENKKKPVINLKSNALWDESDDSNSEIEAALRPRNHNTDDSDDFYD

SEQ ID NO: 8186 - protein, 138 aa, Homo sapiens
MADPATRHLTPTKLPSTPRATCSVVGSLSIHCGSSQLPTAKNRDFPDTIQCAYIHLVSREECEHAYPGQITQNMLCAGDEKYGKDSCQGDSGGPLVCGDHLRGLVSWGNIPCGSKEKPGVYTNVCRYTNWIQKTIQAK

SEQ ID NO: 8187 - protein, 460 aa, Homo sapiens
MGNSEGCNTKKEGDLIAAQARLKDLEALLNSKEAALSTALSEKRTLEGELHDLRGQVAKLEAALGEAKKQLQDEMLRRVDAENRLQTMKEELDFQKNIYSEELRETKRRHETRLVEIDNGKQREFESRLADALQELRAQHEDQVEQYKKELEKTYSAKLDNARQSAERNSNLVGAAHEELQQSRIRIDSLSAQLSQLQKQLAAKEAKLRDLEDSLARERDTSRRLLAEKEREMAEMRARMQQQLDEYQELLDIKLALDMEIHAYRKLLEGEEERLRLSPSPTSQRSRGRASSHSSQTQGGGSVTKKRKLESTESRSSFSQHARTSGRVAVEEVDEEGKFVRLRNKSNEDQSMGNWQIKRQNGDDPLLTYRFPPKFTLKAGQVVTIWAAGAGATHSPPTDLVWKAQNTWGCGNSLRTALINSTGEEVAMRKLVRSVTVVEDDEDEDGDDLLHHHHVSGSRR

SEQ ID NO: 8188 - protein, 388 aa, Homo sapiens
MLEGSWINRREDKLGVYSLVHFSPKMLGSVATTLPLSSSNSSGMPLGYYLSSPQISRVTISTTGQLTSKATVGSCSRVENSLDASPFSVPKKQDESPMIGDGEDYFLSLFGDSKKLTAHSNYTQKTLKYFSMILEEVGQFTSSSLGDVEIAEVNVKGLFVKLINSSLDKEMAIGDHILQQNVNGQTISLYRFLPNIVMQANSTVTVWAAASEAKHQPPSDFLWKEQDKFRASPDCITILCKPNGQAIAWYTPIHWKQAWEKLDADVEFNRCSVVSPTFRKRVFQWTASTATITKEKQDQPKKDISNYQVEQAQVLLKREKEIPPTVFPNRSPWCQNPYVSAHPYCPLIEPHNTSTAGGRLDRQPRTRSTRPNRASGSKKKKTSESQKQ

SEQ ID NO: 8189 - protein, 348 aa, Homo sapiens
MLEGSWINRREDKLGVYSLVHFSPKMLGSVATTLPLSSSNSSGMPLGYYLSSPQISRVTISTTGQLTSKATVGSCSRVENSLDASPFSVPKKQDESPMIGDGEDYFLSLFGDSKKLTAHSNYTQKTLKYFSMILEEVGQFTSSSLGDVEIAEVNVKGLFVKLINSSLDKEMAIGDHILQQNVNGQTISLYRFLPNIVMQANSTVTAIAWYTPIHWKQAWEKLDADVEFNRCSVVSPTFRKRVFQWTASTATITKEKQDQPKKDISNYQVEQAQVLLKREKEIPPTVFPNRSPWCQNPYVSAHPYCPLIEPHNTSTAGGRLDRQPRTRSTRPNRASGSKKKKTSESQKQ

SEQ ID NO: 8190 - protein, 1528 aa, Homo sapiens
MMENLIRGRNPPQYQRSPCKEVRAALRKRPEEELQCLEMTTKRKIIGRLVPCRCFRGEEEIISVLDYSHCSLQQVPKEVFNFERTLEELYLDANQIEELPKQLFNCQALRKLSIPDNDLSNLPTTIASLVNLKELDISKNGVQEFPENIKCCKCLTIIEASVNPISKLPDGFTQLLNLTQLYLNDAFLEFLPANFGRLVKLRILELRENHLKTLPKSMHKLAQLERLDLGNNEFGELPEVLDQIQNLRELWMDNNALQVLPGSIGKLKMLVYLDMSKNRIETVDMDISGCEALEDLLLSSNMLQQLPDSIGLLKKLTTLKVDDNQLTMLPNTIGNLSLLEEFDCSCNELESLPSTIGYLHSLRTLAVDENFLPELPREIGSCKNVTVMSLRSNKLEFLPEEIGQMQKLRVLNLSDNRLKNLPFSFTKLKELAALWLSDNQSKALIPLQTEAHPETKQRVLTNYMFPQQPRGDEDFQSDSDSFNPTLWEEQRQQRMTVAFEFEDKKEDDENAGKVKDLSCQAPWERGQRGITLQPARLSGDCCTPWARCDQQIQDMPVPQNDPQLAWGCISGLQQERSMCTPLPVAAQSTTLPSLSGRQVEINLKRYPTPYPEDLKNMVKSVQNLVGKPSHGVRVENSNPTANTEQTVKEKYEHKWPVAPKEITVEDSFVHPANEMRIGELHPSLAETPLYPPKLVLLGKDKKESTDESEVDKTHCLNNSVSSGTYSDYSPSQASSGSSNTRVKVGSLQTTAKDAVHNSLWGNRIAPSFPQPLDSKPLLSQREAVPPGNIPQRPDRLPMSDTFTDNWTDGSHYDNTGFVAEETTAENANSNPLLSSKSRSTSSHGRRPLIRQDRIVGVPLELEQSTHRHTPETEVPPSNPWQNWTRTPSPFEDRTAFPSKLETTPTTSPLPERKEHIKESTEIPSPFSPGVPWEYHDSNPNRSLSNVFSQIHCRPESSKGVISISKSTERLSPLMKDIKSNKFKKSQSIDEIDIGTYKVYNIPLENYASGSDHLGSHERPDKMLGPEHGMSSMSRSQSVPMLDDEMLTYGSSKGPQQQKASMTKKVYQFDQSFNPQGSVEVKAEKRIPPPFQHNPEYVQQASKNIAKDLISPRAYRGYPPMEQMFSFSQPSVNEDAVVNAQFASQGARAGFLRRADSLVSATEMAMFRRVNEPHELPPTDRYGRPPYRGGLDRQSSVTVTESQFLKRNGRYEDEHPSYQEVKAQAGSFPVKNLTQRRPLSARSYSTESYGASQTRPVSARPTMAALLEKIPSDYNLGNYGDKPSDNSDLKTRPTPVKGEESCGKMPADWRQQLLRHIEARRLDRTPSQQSNILDNGQEDVSPSGQWNPYPLGRRDVPPDTITKKAGSHIQTLMGSQSLQHRSREQQPYEGNINKVTIQQFQSPLPIQIPSSQATRGPQPGRCLIQTKGQRSMDGYPEQFCVRIEKNPGLGFSISGGISGQGNPFKPSDKGIFVTRVQPDGPASNLLQPGDKILQANGHSFVHMEHEKAVLLLKSFQNTVDLVIQRELTV

SEQ ID NO: 8191 - protein, 140 aa, Homo sapiens
MVEFQPSVTDLVNEEPRTGLRPLKRSKSGKSLTQSLWLNNNVLNDLRDFNQVASQLLEHPENLAWIDLSFNDLTSIDPVLTTFFNLSVLYLHGNSIQRLGEVNKLAVLPRLRSLTLHGNPMEEEKGYRVPGSVEMPHRPP

SEQ ID NO: 8192 - protein, 174 aa, Homo sapiens
MVEFQPSVTDLVNEEPRTGLRPLKRSKSGKSLTQSLWLNNNVLNDLRDFNQVASQLLEHPENLAWIDLSFNDLTSIDPVLTTFFNLSVLYLHGNSIQRLGEVNKLAVLPRLRSLTLHGNPMEEEKGYRQYVLCTLSRITTFDFSGVTKADRTTAEVWKRMNIKPKKAWTKQNTL

SEQ ID NO: 8193 - protein, 85 aa, Homo sapiens
MVEFQPSVTDLVNEEPRTGLRPLKRSKSGKSLTQSLWLNNNVLNDLRDFNQVASQLLEHPENLAWIDLSFNDLTSIDPVLTTFFN

SEQ ID NO: 8194 - protein, 20 aa, Homo sapiens
MVEFQPSVTANLKGNRGLSQ

SEQ ID NO: 8195 - protein, 128 aa, Homo sapiens
MVEFQPSVTDLVNEEPRTGLRPLKRSKSGKSLTQSLWLNNNVLNDLRDFNQVASQLLEHPENLAWIDLSFNDLTSIDPVLTTFFNLSVLYLHGNSIQRLGEVNKLAVLPRLRSLTLHGNPMEEEKGYR

SEQ ID NO: 8196 - protein, 174 aa, Homo sapiens; identical to SEQ ID NO: 8192

SEQ ID NO: 8197 - protein, 174 aa, Homo sapiens; identical to SEQ ID NO: 8192

SEQ ID NO: 8198 - protein, 20 aa, Homo sapiens
MVEFQPSVTANLKGNRGLSQ

SEQ ID NO: 8199 - protein, 128 aa, Homo sapiens; identical to SEQ ID NO: 8195

SEQ ID NO: 8200 - protein, 20 aa, Homo sapiens
MVEFQPSVTANLKGNRGLSQ

SEQ ID NO: 8201 - protein, 174 aa, Homo sapiens; identical to SEQ ID NO: 8192

SEQ ID NO: 8202 - protein, 295 aa, Homo sapiens
MRNQDPGKMGRQRKSIKLYPTHPLVTFPRSWAKFQEKALLVEDTFTIDEVSEVLNGLQAVVHSEVESELINTAYTNVLLLRQLFAQAEKWYLKLQTDISELENRELLEQVAEFEKAEITSSNKKPILDVTKPKLAPLNEGGTAELLNKEILRLQEENEKLKSRLKTIEIQATNALDEKSKLEKALQDLQLDQGNQKDFIKAQDLSNLENTVAALKSEFQKTLNDKTENQKSLEENLATAKHDLLRVQEQLHMAEKELEKKFQQTAAYRNMKEILTKKNDQIKDLRKRLAQYEPED

SEQ ID NO: 8203 - protein, 492 aa, Homo sapiens
MELEKSGALLESGTYEDNYYGTPKPPAEPAPLLLNVTDQILPGATPSAEGKRKRNKSVSNMEKASIEPPEEEEEERPVVNGNGVVVTPESSEHEDKSAGASGEMPSQPYPAPVYSQPEELKEQMDDTKPTKPEDNEEPDPLPDNWEMAYTEKGEVYFIDHNTKTTSWLDPRLAKKAKPPEECKENELPYGWEKIDDPIYGTYYVDHINRRTQFENPVLEAKRKLQQHNMPHTELGTKPLQAPGFREKPLFTRDASQLKGTFLSTTLKKSNMGFGFTIIGGDEPDEFLQVKSVIPDGPAAQDGKMETGDVIVYINEVCVLGHTHADVVKLFQSVPIGQSVNLVLCRGYPLPFDPEDPANSMVPPLAIMERPPPVMVNGRHNYETYLEYISRTSQSVPDITDRPPHSLHSMPTDGQLDGTYPPPVHDDNVSMASSGATQAELMTLTIVKGAQGFGFTIADSPTGQRVKQILDIQGCPGLCEGDLIVEINQQNVQ

SEQ ID NO: 8204 - protein, 184 aa, Homo sapiens
MAAAAAAAPSGGGGGGEEERLEEKSEDQDLQGLKDKPLKFKKVKKDKKEEKEGKHEPVQPSAHHSAEPAEAGKAETSEGSGSAPAVPEASASPKQRRSIIRDRGPMYDDPTLPEGWTRKLKQRKSGRSAGKYDVYLINPQGKAFRSKVELIAYFEKLQELAEAGDAPKGAAPRDPRRPRQRVCR

SEQ ID NO: 8205 - protein, 498 aa, Homo sapiens [sequence omitted]

SEQ ID NO: 8206 - protein, 825 aa, Homo sapiens
MGPAPLPLLLGLFLPALWRRGLPHFTKQPESMNVTRNTAFNLTCQAVGPPEPVNIFWVQNSSRVNEQPEKSPSVLTVPGLTEMAVFSCEAHNDKGLTVSKGVQINIKAIPSPPTEVSIRNSTAHSILISWVPGFDGYSPFRNCSIQVKEADPLSNGSVMIFNTSALPHLYQIKQLQALANYSIGVSCMNEIGWSAVSPWILASTTEGAPSVAPLNVTVFLNESSDNVDIRWMKPPTKQQDGELVGYRISHVWQSAGISKELLEEVGQNGSRARISVQVHNATCTVRIAAVTRGGVGPFSDPVKIFIPAHGWVDYAPSSTPAPGNADPVLIIFGCFCGFILIGLILYISLAIRKRVQETKFGNAFTEEDSELVVNYIAKKSFCRRAIELTLHSLGVSEELQNKLEDVVIDRNLLILGKILGEGEFGSVMEGNLKQEDGTSLKVAVKTMKLDNSSQREIEEFLSEAACMKDFSHPNVIRLLGVCIEMSSQGIPKPMVILPFMKYGDLHTYLLYSRLETGPKHIPLQTLLKFMVDIALGMEYLSNRNFLHRDLAARNCMLRDDMTVCVADFGLSKKIYSGDYYRQGRIAKMPVKWIAIESLADRVYTSKSDVWAFGVTMWEIATRGMTPYPGVQNHEMYDYLLHGHRLKQPEDCLDELYEIMYSCWRTDPLDRPTFSVLRLQLEKLLESLPDVRNQADVIYVNTQLLESSEGLAQGSTLAPLDLNIDPDSIIASCTPRAAISVVTAEVHDSKPHEGRYILNGGSEEWEDLTSAPSAAVTAEKNSVLPGERLVRNGVSWSHSSMLPLGSSLPDELLFADDSSEGSEVLM

SEQ ID NO: 8207 - protein, 402 aa, Homo sapiens
MAKGEGAESGSAAGLLPTSILQSTERPAQVKCFHVPYSALTMFISTEQTERDSATAYRMTVEVLGTVLGTAIQGQIVGQADTPCFQDLNSSTVASQSANHTHGTTSHRETQKAYLLAAGVIVCIYIICAVILILGVREQREPYEAQQSEPIAYFRGLRLVMSHGPYIKLITGFLFTSLAFMLVEGNFVLFCTYTLGFRNEFQNLLLAIMLSATLTIPIWQWFLTRFGKKTAVYVGISSAVPFLILVALMESNLIITYAVAVAAGISVAAAFLLPWSMLPDVIDDFHLKQPHFHGTEPIFFSFYVFFTKFASGVSLGISTLSLDFAGYQTRGCSQPERVKFTLNMLVTMAPIVLILLGLLLFKMYPIDEERRRQNKKALQALRDEASSSGCSETDSTELASIL

SEQ ID NO: 8208 - protein, 264 aa, Homo sapiens
MFRMLNSSFEDDPFFSANLVCEGTPLSVKTRNRTGKLMGRGGGRGAGGGRRGGGGVYLTPQHTDVSSFQTMDQMVSNMRNYMQKLERNFGQLSVDPNGHSFCSSSVMTYSKIGDEPPKVFQASTQTRRAPGGIKETRKAMRDSDSGLEKMAIGHHIHDRAHVIKKSKNKKTGDEEVNQEFINMNESDAHAFDEEWQSEVLKYKPGRHNLGNTRMRSVGHENPGSRELKRREKPQQSPAIEHGRRSNVLGDKLHIKGSSVKSNKK

SEQ ID NO: 8209 - protein, 238 aa, Homo sapiens
MTPSSRELREPGVRGRAGIKATSCSLVPFGDFGGMHTDVSSFQTMDQMVSNMRNYMQKLERNFGQLSVDPNGHSFCSSSVMTYSKIGDEPPKVFQASTQTRRAPGGIKETRKAMRDSDSGLEKMAIGHHIHDRAHVIKKSKNKKTGDEEVNQEFINMNESDAHAFDEEWQSEVLKYKPGRHNLGNTRMRSVGHENPGSRELKRREKPQQSPAIEHGRRSNVLGDKLHIKGSSVKSNKK

SEQ ID NO: 8210 - protein, 223 aa, Homo sapiens
MTPSSRELREPGVRGRAGIKHTDVSSFQTMDQMVSNMRNYMQKLERNFGQLSVDPNGHSFCSSSVMTYSKIGDEPPKVFQASTQTRRAPGGIKETRKAMRDSDSGLEKMAIGHHIHDRAHVIKKSKNKKTGDEEVNQEFINMNESDAHAFDEEWQSEVLKYKPGRHNLGNTRMRSVGHENPGSRELKRREKPQQSPAIEHGRRSNVLGDKLHIKGSSVKSNKK

SEQ ID NO: 8211 - protein, 180 aa, Homo sapiens
MTPSSRELREPGVRGRAGIKHTDVSSFQTMDQMVSNMRNYMQKLERNFIKETRKAMRDSDSGLEKMAIGHHIHDRAHVIKKSKNKKTGDEEVNQEFINMNESDAHAFDEEWQSEVLKYKPGRHNLGNTRMRSVGHENPGSRELKRREKPQQSPAIEHGRRSNVLGDKLHIKGSSVKSNKK

SEQ ID NO: 8212 - protein, 154 aa, Homo sapiens
MTPSSRELREPGVRGRAGIKATSCSLVPFGDFGGMHTDVSSFQTMDQMVSNMRNYMQKLERNFGQLSVDPNGHSFCSSSVMTYSKIGDEPPKVFQASTQTRRAPGGIKETRKAMRDSDSGLEKMAIGHHIHDRAHVIKKSKNKKTGDEEVNQEF

SEQ ID NO: 8213 - protein, 216 aa, Homo sapiens
MSFLFGSRSSKTFKPKKNIPEGSHQYELLKHAEATLGSGNLRMAVMLPEGEDLNEWVAVNTVDFFNQINMLYGTITDFCTEESCPVMSAGPKYEYHWADGTNIKKPIKCSAPKYIDYLMTWVQDQLDDETLFPSKIGVPFPKNFMSVAKTILKRLFRVYAHIYHQHFDPVIQLQEEAHLNTSFKHFIFFVQEFNLIDRRELAPLQELIEKLTSKDR

SEQ ID NO: 8214 - protein, 192 aa, Homo sapiens
MSPRRTLPRPLSLCLSLCLCLCLAAALGSAQSGSCRDKKNCKVVFSQQELRKRLTPLQYHVTQEKGTESAFEGEYTHHKDPGIYKCVVCGTPLFKSETKFDSGSGWPSFHDVINSEAITFTDDFSYGMHRVETSCSQCGAHLGHIFDDGPRPTGKRYCINSAALSFTPADSSGTAEGGSGVASPAQADKAEL

SEQ ID NO: 8215 - protein, 90 aa, Homo sapiens
MLPKRSRRTVSKSIGPTCPFAGSCEVSKTQRRHCPACRLQKCLDAGMRKDTSSSSVHPSPALAHPGPCAASGHTLRRHQHFHGTASHQVY

SEQ ID NO: 8216 - protein, 209 aa, Homo sapiens
MLPKRSRRTVSKSIGPTCPFAGSCEVSKTQRRHCPACRLQKCLDAGMRKDMILSAEALALRRAKQAQRRAQQTPVQLSKEQEELIRTLLGAHTRHMGTMFEQFVQFRPPAHLFIHHQPLPTLAPVLPLVTHFADINTFMVLQVIKFTKDLPVFRSLPIEDQISLLKGAAVEICHIVLNTTFCLQTQNFLCGPLRYTIEDGARGEMVLEQ

SEQ ID NO: 8217 - protein, 319 aa, Homo sapiens
MLPKRSRRTVSKSIGPTCPFAGSCEVSKTQRRHCPACRLQKCLDAGMRKDMILSAEALALRRAKQAQRRAQQTPVQLSKEQEELIRTLLGAHTRHMGTMFEQFVQFRPPAHLFIHHQPLPTLAPVLPLVTHFADINTFMVLQVIKFTKDLPVFRSLPIEDQISLLKGAAVEICHIVLNTTFCLQTQNFLCGPLRYTIEDGARVGFQVEFLELLFHFHGTLRKLQLQEPEYVLLAAMALFSPDRPGVTQRDEIDQLQEEMALTLQSYIKGQQRRPRDRFLYAKLLGLLAELRSINEAYGYQIQHIQGLSAMMPLLQEICS

SEQ ID NO: 8218 - protein, 323 aa, Homo sapiens
MLPKRSRRTVSKSIGPTCPFAGSCEVSKTQRRHCPACRLQKCLDAGMRKDMILSAEALALRRAKQAQRRAQQTPVQLSKEQEELIRTLLGAHTRHMGTMFEQFVQFRPPAHLFIHHQPLPTLAPVLPLVTHFADINTFMVLQVIKFTKDLPVFRSLPIEDQISLLKGAAVEICHIVLNTTFCLQTQNFLCGPLRYTIEDGARVSPTVGFQVEFLELLFHFHGTLRKLQLQEPEYVLLAAMALFSPDRPGVTQRDEIDQLQEEMALTLQSYIKGQQRRPRDRFLYAKLLGLLAELRSINEAYGYQIQHIQGLSAMMPLLQEICS

SEQ ID NO: 8219 - protein, 118 aa, Homo sapiens
MLPKRSRRTVSKSIGPTCPFAGSCEVSKTQRRHCPACRLQKCLDAGMRKDIPCPLKTRSPFSREQLWKSVTSYSIPLSVSKHKTSSAGLFATQLKMEPVTDLELPREMRLISCKRRWH

SEQ ID NO: 8220 - protein, 328 aa, Homo sapiens
MLPKRSRRTVSKSIGPTCPFAGSCEVSKTQRRHCPACRLQKCLDAGMRKDMILSAEALALRRAKQAQRRAQQTPVQLSKEQEELIRTLLGAHTRHMGTMFEQFVQFRPPAHLFIHHQPLPTLAPVLPLVTHFADINTFMVLQVIKFTKDLPVFRSLPIEDQISLLKGAAVEICHIVLNTTFCLQTQNFLCGPLRYTIEDGARVSPTVGFQVEFLELLFHFHGTLRKLQLQEPEYVLLAAMALFSPAPYLTDRPGVTQRDEIDQLQEEMALTLQSYIKGQQRRPRDRFLYAKLLGLLAELRSINEAYGYQIQHIQGLSAMMPLLQEICS

SEQ ID NO: 8221 - protein, 280 aa, Homo sapiens
MLPKRSRRTVSKSIGPTCPFAGSCEVSKTQRRHCPACRLQKCLDAGMRKDMILSAEALALRRAKQAQRRAQQTPVQLSKEQEELIRTLLGAHTRHMGTMFEQFVQFRPPAHLFIHHQPLPTLAPVLPLVTHFADINTFMVLQVIKFTKDLPVFRSLPIEDQISLLKGAAVEICHIVLNTTFCLQTQNFLCGPLRYTIEDGARDRPGVTQRDEIDQLQEEMALTLQSYIKGQQRRPRDRFLYAKLLGLLAELRSINEAYGYQIQHIQGLSAMMPLLQEICS

SEQ ID NO: 8222 - protein, 267 aa, Homo sapiens
MLPKRSRRTVSKSIGPTCPFAGSCEVSKTQRRHCPACRLQKCLDAGMRKDMILSAEALALRRAKQAQRRAQQTPVQLSKEQEELIRTLLGAHTRHMGTMFEQFVQFRPPAHLFIHHQPLPTLAPVLPLVTHFADINTFMVLQVIKFTKDLPVFRSLPIEDQISLLKGAAVEICHIVLNTTFCLQTQNFLCGPLRYTIEDGARDRPGVTQRDEIDQLQEEMALTLQSYIKGQQRRPRDRSPGTPWIHWSGKMLGPKIGPGSKGAQWLQ

SEQ ID NO: 8223 - protein, 118 aa, Homo sapiens; identical to SEQ ID NO: 8219

SEQ ID NO: 8224 - protein, 311 aa, Homo sapiens
MLPKRSRRTVSKSIGPTCPFAGSCEVSKTQRRHCPACRLQKCLDAGMRKDMILSAEALALRRAKQAQRRAQQTPVQLSKEQEELIRTLLGAHTRHMGTMFEQFVQFRPPAHLFIHHQPLPTLAPVLPLVTHFADINTFMVLQVIKFTKDLPVFRSLPIEDQISLLKGAAVEICHIVLNTTFCLQTQNFLCGPLRYTIEDGARVGFQVEFLELLFHFHGTLRKLQLQEPEYVLLAAMALFSPAPYLTDRPGVTQRDEIDQLQEEMALTLQSYIKGQQRRPRDRSPGTPWIHWSGKMLGPKIGPGSKGAQWLQ

SEQ ID NO: 8225 - protein, 285 aa, Homo sapiens
MLPKRSRRTVSKSIGPTCPFAGSCEVSKTQRRHCPACRLQKCLDAGMRKDMILSAEALALRRAKQAQRRAQQTPVQLSKEQEELIRTLLGAHTRHMGTMFEQFVQFRPPAHLFIHHQPLPTLAPVLPLVTHFADINTFMVLQVIKFTKDLPVFRSLPIEDQISLLKGAAVEICHIVLNTTFCLQTQNFLCGPLRYTIEDGARAPYLTDRPGVTQRDEIDQLQEEMALTLQSYIKGQQRRPRDRFLYAKLLGLLAELRSINEAYGYQIQHIQGLSAMMPLLQEICS

SEQ ID NO: 8226 - protein, 90 aa, Homo sapiens; identical to SEQ ID NO: 8215

SEQ ID NO: 8227 - protein, 310 aa, Homo sapiens
MLPKRSRRTVSKSIGPTCPFAGSCEVSKTQRRHCPACRLQKCLDAGMRKDMILSAEALALRRAKQAQRRAQQTPVQLSKEQEELIRTLLGAHTRHMGTMFEQFVQFRPPAHLFIHHQPLPTLAPVLPLVTHFADINTFMVLQVIKFTKDLPVFRSLPIEDQISLLKGAAVEICHIVLNTTFCLQTQNFLCGPLRYTIEDGARVSPTVGFQVEFLELLFHFHGTLRKLQLQEPEYVLLAAMALFSPDRPGVTQRDEIDQLQEEMALTLQSYIKGQQRRPRDRSPGTPWIHWSGKMLGPKIGPGSKGAQWLQ

SEQ ID NO: 8228 - protein, 336 aa, Homo sapiens
MRAPSMDRAAVARVGAVASASVCALVAGVVLAQYIFTLKRKTGRKTKIIEMMPEFQKSSVRIKNPTRVEEIICGLIKGGAAKLQIITDFDMTLSRFSYKGKRCPTCHNIIDNCKLVTDECRKKLLQLKEKYYAIEVDPVLTVEEKYPYMVEWYTKSHGLLVQQALPKAKLKEIVAESDVMLKEGYENFFDKLQQHSIPVFIFSAGIGDVLEEVIRQAGVYHPNVKVVSNFMDFDETGVLKGFKGELIHVFNKHDGALRNTEYFNQLKDNSNIILLGDSQGDLRMADGVANVEHILKIGYLNDRVDELLEKYMDSYDIVLVQDESLEVANSILQKIL

SEQ ID NO: 8229 - protein, 331 aa, Homo sapiens
MDRAAVARVGAVASASVCALVAGVVLAQYIFTLKRKTGRKTKIIEMMPEFQKSSVRIKNPTRVEEIICGLIKGGAAKLQIITDFDMTLSRFSYKGKRCPTCHNIIDNCKLVTDECRKKLLQLKEKYYAIEVDPVLTVEEKYPYMVEWYTKSHGLLVQQALPKAKLKEIVAESDVMLKEGYENFFDKLQQHSIPVFIFSAGIGDVLEEVIRQAGVYHPNVKVVSNFMDFDETGVLKGFKGELIHVFNKHDGALRNTEYFNQLKDNSNIILLGDSQGDLRMADGVANVEHILKIGYLNDRVDELLEKYMDSYDIVLVQDESLEVANSILQKIL

SEQ ID NO: 8230 - protein, 1150 aa, Homo sapiens
MFQRSNQDLKLGPYRKFSALSYGASALPGPDMSMKPSAAPSPSPALPFLPPTSDPPDHPPREPPPQPIMPSVFSPDNPLMLSAFPSSLLVTGDGGPCLSGAGAGKVIVKVKTEGGSAEPSQTQNFILTQTALNSTAPGTPCGGLEGPAPPFVTASNVKTILPSKAVGVSQEGPPGLPPQPPPPVAQLVPIVPLEKAWPGPHGTTGEGGPVATLSKPSLGDRSKISKDVYENFRQWQRYKALARRHLSQSPDTEALSCFLIPVLRSLARLKPTMTLEEGLPLAVQEWEHTSNFDRMIFYEMAERFMEFEAEEMQIQNTQLMNGSQGLSPATPLKLDPLGPLASEVCQQPVYIPKKAASKTRAPRRRQRKAQRPPAPEAPKEIPPEAVKEYVDIMEWLVGTHLATGESDGKQEEEGQQQEEEGMYPDPGLLSYINELCSQKVFVSKVEAVIHPQFLADLLSPEKQRDPLALIEELEQEEGLTLAQLVQKRLMALEEEEDAEAPPSFSGAQLDSSPSGSVEDEDGDGRLRPSPGLQGAGGAACLGKVSSSGKRAREVHGGQEQALDSPRGMHRDGNTLPSPSSWDLQPELAAPQGTPGPLGVERRGSGKVINQVSLHQDGHLGGAGPPGHCLVADRTSEALPLCWQGGFQPESTPSLDAGLAELAPLQGQGLEKQVLGLQKGQQTGGRGVLPQGKEPLAVPWEGSSGAMWGDDRGTPMAQSYDQNPSPRAAGERDDVCLSPGVWLSSEMDAVGLELPVQIEEVIESFQVEKCVTEYQEGCQGLGSRGNISLGPGETLVPGDTESSVIPCGGTVAAAALEKRNYCSLPGPLRANSPPLRSKENQEQSCETVGHPSDLWAEGCFPLLESGDSTLGSSKETLPPTCQGNLLIMGTEDASSLPEASQEAGSRGNSFSPLLETIEPVNILDVKDDCGLQLRVSEDTCPLNVHSYDPQGEGRVDPDLSKPKNLAPLQESQESYTTGTPKATSSHQGLGSTLPRRGTRNAIVPRETSVSKTHRSADRAKGKEKKKKEAEEEDEELSNFAYLLASKLSLSPREHPLSPHHASGGQGSQRASHLLPAGAKGPSKLPYPVAKSGKRALAGGPAPTEKTPHSGAQLGVPREKPLALGVVRPSQPRKRRCDSFVTGRRKKRRRSQ

SEQ ID NO: 8231 - protein, 1222 aa, Homo sapiens
MMTDTQDGPSESSQIMSRFLSLADKDQGHSSRTRLDRERLKSCMRELENMGQQARMLRAQVKRHTVRDKLRLCQNFLQKLRFLADEPQHSIPDIFIWMMSNNKRVAYARVPSKDLLFSIVEEETGKDCAKVKTLFLKLPGKRGFGSAGWTVQAKVELYLWLGLSKQRKEFLCGLPCGFQEVKAAQGLGLHAFPPVSLVYTKKQAFQLRAHMYQARSLFAADSSGLSDPFARVFFINQSQCTEVLNETLCPTWDQMLVFDNLELYGEAHELRDDPPIIVIEIYDQDSMGKADFMGRTFAKPLVKMADEAYCPPRFPPQLEYYQIYRGNATAGDLLAAFELLQIGPAGKADLPPINGPVDVDRGPIMPVPMGIRPVLSKYRVEVLFWGLRDLKRVNLAQVDRPRVDIECAGKGVQSSLIHNYKKNPNFNTLVKWFEVDLPENELLHPPLNIRVVDCRAFGRYTLVGSHAVSSLRRFIYRPPDRSAPSWNTTGEVVVTMEPEVPIKKLETMVKLDATSEAVVKVDVAEEEKEKKKKKKGTAEEPEEEEPDESMLDWWSKYFASIDTMKEQLRQQEPSGIDLEEKEEVDNTEGLKGSMKGKEKARAAKEEKKKKTQSSGSGQGSEAPEKKKPKIDELKVYPKELESEFDNFEDWLHTFNLLRGKTGDDEDGSTEEERIVGRFKGSLCVYKVPLPEDVSREAGYDSTYGMFQGIPSNDPINVLVRVYVVRATDLHPADINGKADPYIAIRLGKTDIRDKENYISKQLNPVFGKSFDIEASFPMESMLTVAVYDWDLVGTDDLIGETKIDLENRFYSKHRATCGIAQTYSTHGYNIWRDPMKPSQILTRLCKDGKVDGPHFGPPGRVKVANRVFTGPSEIEDENGQRKPTDEHVALLALRHWEDIPRAGCRLVPEHVETRPLLNPDKPGIEQGRLELWVDMFPMDMPAPGTPLDISPRKPKKYELRVIIWNTDEVVLEDDDFFTGEKSSDIFVRGWLKGQQEDKQDTDVHYHSLTGEGNFNWRYLFPFDYLAAEEKIVISKKESMFSWDETEYKIPARLTLQIWDADHFSADDFLGAIELDLNRFPRGAKTAKQCTMEMATGEVDVPLVSIFKQKRVKGWWPLLARNENDEFELTGKVEAELHLLTAEEAEKNPVGLARNEPDPLEKPNRPDTSFIWFLNPLKSARYFLWHTYRWLLLKLLLLLLLLLLLALFLYSVPGYLVKKILGA

SEQ ID NO: 8232 - protein, 1222 aa, Homo sapiens
MMTDTQDGPSESSQIMSRFLSLADKDQGHSSRTRLDRERLKSCMRELENMGQQARMLRAQVKRHTVRDKLRLCQNFLQKLRFLADEPQHSIPDIFIWMMSNNKRVAYARVPSKDLLFSIVEEETGKDCAKVKTLFLKLPGKRGFGSAGWTVQAKVELYLWLGLSKQRKEFLCGLPCGFQEVKAAQGLGLHAFPPVSLVYTKKQAFQLRAHMYQARSLFAADSSGLSDPFARVFFINQSQCTEVLNETLCPTWDQMLVFDNLELYGEAHELRDDPPIIVIEIYDQDSMGKADFMGRTFAKPLVKMADEAYCPPRFPPQLEYYQIYRGNATAGDLLAAFELLQIGPAGKADLPPINGPVDVDRGPIMPVPMGIRPVLSKYRVEVLFWGLRDLKRVNLAQVDRPRVDIECAGKGVQSSLIHNYKKNPNFNTLVKWFEVDLPENELLHPPLNIRVVDCRAFGRYTLVGSHAVSSLRRFIYRPPDRSAPSWNTTGEVVVTMEPEVPIKKLETMVKLDATSEAVVKVDVAEEEKEKKKKKKGTAEEPEEEEPDESMLDWWSKYFASIDTMKEQLRQQEPSGIDLEEKEEVDNTEGLKGSMKGKEKARAAKEEKKKKTQSSGSGQGSEAPEKKKPKIDELKVYPKELESEFDNFEDWLHTFNLLRGKTGDDEDGSTEEERIVGRFKGSLCVYKVPLPEDVSREAGYDSTYGMFQGIPSNDPINVLVRVYVVRATDLHPADINGKADPYIAIRLGKTDIRDKENYISKQLNPVFGKSFDIEASFPMESMLTVAVYDWDLVGTDDLIGETKIDLENRFYSKHRATCGIAQTYSTHGYNIWRDPMKPSQILTRLCKDGKVDGPHFGPPGRVKVANRVFTGPSEIEDENGQRKPTDEHVALLALRHWEDIPRAGCRLVPEHVETRPLLNPDKPGIEQGRLELWVDMFPMDMPAPGTPLDISPRKPKKYELRVIIWNTDEVVLEDDDFFTGEKSSDIFVRGWLKGQQEDKQDTDVHYHSLTGEGNFNWRYLFPFDYLAAEEKIVISKKESMFSWDETEYKIPARLTLQIWDADHFSADDFLGAIELDLNRFPRGAKTAKQCTMEMATGEVDVPLVSIFKQKRVKGWWPLLARNENDEFELTGKVEAELHLLTAEEAEKNPVGLARNEPDPLEKPNRPDTAFVWFLNPLKSIKYLICTRYKWLIIKIVLALLGLLMLGLFLYSLPGYMVKKLLGA

SEQ ID NO: 8233 - protein, 469 aa, Homo sapiens
MDVENEQILNVNPADPDNLSDSLFSGDEENAGTEEIKNEINGNWISASSINEARINAKAKRRLRKNSSRDSGRGDSVSDSGSDALRSGLTVPTSPKGRLLDRRSRSGKGRGLPKKGGAGGKGVWGTPGQVYDVEEVDVKDPNYDDDQENCVYETVVLPLDERAFEKTLTPIIQEYFEHGDTNEVAEMLRDLNLGEMKSGVPVLAVSLALEGKASHREMTSKLLSDLCGTVMSTTDVEKSFDKLLKDLPELALDTPRAPQLVGQFIARAVGDGILCNTYIDSYKGTVDCVQARAALDKATVLLSMSKGGKRKDSVWGSGGGQQSVNHLVKEIDMLLKEYLLSGDISEAEHCLKELEVPHFHHELVYEAIIMVLESTGESTFKMILDLLKSLWKSSTITVDQMKRGYERIYNEIPDINLDVPHSYSVLERFVEECFQAGIISKQLRDLCPSRGRKRFVSEGDGGRLKPESY

SEQ ID NO: 8234 - protein, 73 aa, Homo sapiens
MARTTSQLPGPTHSWEQRSTFLQSCSRRSPPVRDLWALGCIIYQLVAGLPPFRAGNEYLIFQKIIKLEYDFPE

SEQ ID NO: 8235 - protein, 236 aa, Homo sapiens
MAGAAGLTAEVSWKVLERRARTKRSGSVYEPLKSINLPRPDNETLWDKLDHYYRIVKSTLLLYQSPTTGLFPTKTCGGDQKAKIQDSLYCAAGAWALALAYRRIDDDKGRTHELEHSAIKCMRGILYCYMRQADKVQQFKQDPRPTTCLHSVFNVHTGDELLSYEEYGHLQINAVSLYLLYLVEMISSGLQIIYNTDEVSFIQNLVFCVERVYRVPDFGVWERGSKYNNGSTELHS

SEQ ID NO: 8236 - protein, 1093 aa, Homo sapiens
MAGAAGLTAEVSWKVLERRARTKRSGSVYEPLKSINLPRPDNETLWDKLDHYYRIVKSTLLLYQSPTTGLFPTKTCGGDQKAKIQDSLYCAAGAWALALAYRRIDDDKGRTHELEHSAIKCMRGILYCYMRQADKVQQFKQDPRPTTCLHSVFNVHTGDELLSYEEYGHLQINAVSLYLLYLVEMISSGLQIIYNTDEVSFIQNLVFCVERVYRVPDFGVWERGSKYNNGSTELHSSSVGLAKAALEAINGFNLFGNQGCSWSVIFVDLDAHNRNRQTLCSLLPRESRSHNTDAALLPCISYPAFALDDEVLFSQTLDKVVRKLKGKYGFKRFLRDGYRTSLEDPNRCYYKPAEIKLFDGIECEFPIFFLYMMIDGVFRGNPKQVQEYQDLLTPVLHHTTEGYPVVPKYYYVPADFVEYEKNNPGSQKRFPSNCGRDGKLFLWGQALYIIAKLLADELISPKDIDPVQRYVPLKDQRNVSMRFSNQGPLENDLVVHVALIAESQRLQVFLNTYGIQTQTPQQVEPIQIWPQQELVKAYLQLGINEKLGLSGRPDRPIGCLGTSKIYRILGKTVVCYPIIFDLSDFYMSQDVFLLIDDIKNALQFIKQYWKMHGRPLFLVLIREDNIRGSRFNPILDMLAALKKGIIGGVKVHVDRLQTLISGAVVEQLDFLRISDTEELPEFKSFEELEPPKHSKVKRQSSTPSAPELGQQPDVNISEWKDKPTHEILQKLNDCSCLASQAILLGILLKREGPNFITKEGTVSDHIERVYRRAGSQKLWSVVRRAASLLSKVVDSLAPSITNVLVQGKQVTLGAFGHEEEVISNPLSPRVIQNIIYYKCNTHDEREAVIQQELVIHIGWIISNNPELFSGMLKIRIGWIIHAMEYELQIRGGDKPALDLYQLSPSEVKQLLLDILQPQQNGRCWLNRRQIDGSLNRTPTGFYDRVWQILERTPNGIIVAGKHLPQQPTLSDMTMYEMNFSLLVEDTLGNIDQPQYRQIVVELLMVVSIVLERNPELEFQDKVDLDRLVKEAFNEFQKDQSRLKEIEKQDDMTSFYNTPPLGKRGTCSYLTKAVMNLLLEGEVKPNNDDPCLIS

SEQ ID NO: 8237 - protein, 250 aa, Homo sapiens
MELTGIDLLSGIIPELCQKYPDLNFIIGGEGPKRIILEEVRERYQLHDRVRLLGALEHKDVRNVLVQGHIFLNTSLTEAFCMAIVEAASCGLQVVSTRVGGIPEVLPENLIILCEPSVKSLCEGLEKAIFQLKSGTLPAPENIHNIVKTFYTWRNVAERTEKVYDRVSVEAVLPMDKRLDRLISHCGPVTGYIFALLAVFNFLFLIFLRWMTPDSIIDVAIDATGPRGAWTNNYSHSKRGGENNEISETR

SEQ ID NO: 8238 - protein, 40 aa, Homo sapiens
MELTDGVSLCLPGWSAVAQSRLTANSASRVHAILLPQPPE

SEQ ID NO: 8239 - protein, 758 aa, Homo sapiens
MGGCTVKPQLLLLALVLHPWNPCLGADSEKPSSIPTGEHPAVRRCPARLGRRGGSSFIHQPFRGAGQVLGQGEEWRGGDGINSIGGGQKVRLMKEVMEHYADQDDLVVMFTECFDVIFAGGPEEVLKKFQKANHKVVFAADGILWPDKRLADKYPVVHIGKRYLNSGGFIGYAPYVNRIVQQWNLQDNDDDQLFYTKVYIDPLKREAINITLDHKCKIFQTLNGAVDEVVLKFENGKARAKNTFYETLPVAINGNGPTKILLNYFGNYVPNSWTQDNGCTLCEFDTVDLSAVDVHPNVSIGVFIEQPTPFLPRFLDILLTLDYPKEALKLFIHNKEVYHEKDIKVFFDKAKHEIKTIKIVGPEENLSQAEARNMGMDFCRQDEKCDYYFSVDADVVLTNPRTLKILIEQNRKIIAPLVTRHGKLWSNFWGALSPDGYYARSEDYVDIVQGNRVGVWNVPYMANVYLIKGKTLRSEMNERNYFVRDKLDPDMALCRNAREMTLQREKDSPTPETFQMLSPPKGVFMYISNRHEFGRLLSTANYNTSHYNNDLWQIFENPVDWKEKYINRDYSKIFTENIVEQPCPDVFWFPIFSEKACDELVEEMEHYGKWSGGKHHDSRISGGYENVPTDDIHMKQVDLENVWLHFIREFIAPVTLKVFAGYYTKGFALLNFVVKYSPERQRSLRPHHDASTFTINIALNNVGEDFQGGGCKFLRYNCSIESPRKGWSFMHPGRLTHLHEGLPVKNGTRYIAVSFIDP

SEQ ID NO: 8240 - protein, 121 aa, Homo sapiens
MSDNEDNFDGDDFDDVEEDEGLDDLENAEEEGQENVEILPSGERPQANQKRITTPYMTKYERARVLGTRALQIAMCAPVMVELEGETDPLLIAMKELKARKIPIIIRRYLPDGSYEDWGVD

SEQ ID NO: 8241 - protein, 137 aa, Homo sapiens
MAPLDLDKYVEIARLCKYLPENDLKRLCDYVCDLLLEESNVQPVSTPVTVCGDIHGQFYDLCELFRTGGQVPDTNYIFMGDFVDRGYYSLETFTYLLALKAKWPDRITLLRGNHESRQITQVYGFYDECQTKYGNAN

SEQ ID NO: 8242 - protein, 162 aa, Homo sapiens
MIAGRSIYNSFYVYCKGPCQRVQPGKLRVQCSTCRQATLTLTQGPSCWDDVLIPNRMSGECQSPHCPGTSAEFFFKCGAHPTSDKETSVALHLIATNSRNITCITCTDVRSPVLVFQCNSRHVICLDCFHLYCVTRLNDRQFVHDPQLGYSLPCVVCLLPGM

SEQ ID NO: 8243 - protein, 186 aa, Homo sapiens
MEDYLQGCRAALQESRPLHVVLGNEACDLDSTVSALALAFYLAKICEVLERSHSPPLKLTPASSTHPNLHAYLQGNTQVSRKKLLPLLQEALSAYFDSMKIPSGQPETADVSREQVDKELDRASNSLISGLSQDEEDPPLPPTPMNSLVDECPLDQGLPKLSAEAVFEKCSQISLSQSTTASLSKK

SEQ ID NO: 8244 - protein, 187 aa, Homo sapiens
MSRGSSAGFDRHITIFSPEGRLYQVADSRSQVQRARYEAANWKYKYGYEIPVDMLCKRIADISQVYTQNAEMRPLGCCMILIGIDEEQGPQVYKCDPAGYYCGFKATAAGVKQTESTSFLEKKVKKKFDWTFEQTVETAITCLSTVLSIDFKPSEIEVGVVTVENPKFRILTEAEIDAHLVALAERD

SEQ ID NO: 8245 - protein, 73 aa, Homo sapiens
MYGKQKIYFADQDQFDMVYRERQKYCKEWRKRKRMATELSDAILEGYPKSKKQFFEEVGIETDEDYNVTLPDP

SEQ ID NO: 8246 - protein, 371 aa, Homo sapiens
MEMEKEFEQIDKSGSWAAIYQGPLPNTCGHFWEMVWEQKSRGVVMLNRVMEKGSLKCAQYWPQKEEKEMIFEDTNLKLTLISEDIKSYYTVRQLELENLTTQETREILHFHYTTWPDFGVPESPASFLNFLFKVRESGSLSPEHGPVVVHCSAGIGRSGTFCLADTCLLLMDKRKDPSSVDIKKVLLEMRKFRMGLIQTADQLRFSYLAVIEGAKFIMGDSSVQDQWKELSHEDLEPPPEHIPPPPRPPKRILEPHNGKCREFFPNHQWVKEETQEDKDCPIKEEKGSPLNAAPYGIESMSQDTEVRSRVVGGSLRGAQAASPAKGEPSLPEKDEDHALSYWKPFLVNMCVATVLTAGAYLCYRFLFNSNT

SEQ ID NO: 8247 - protein, 49 aa, Homo sapiens
MGTRDDEYDYLFKEKNNLSFIETSALDSTNVEEAFKNILTGGRGPDGCG

SEQ ID NO: 8248 - protein, 163 aa, Homo sapiens
MGGCRKFGERPPPKRLTREAMRNYLKERGDQTVLILHAKVAQKSYGNEKRFFCPPPCVYLMGSGWKKKKEQMERDGCSEQESQPCAFIGIGNSDQEMQQLNLEGKNYCTAKTLYISDSDKRKHFMLSVKMFYGNSDDIGVFLSKRIKVISKPSKKKQSLKNAD

SEQ ID NO: 8249 - protein, 485 aa, Homo sapiens
MGGCRKFGERPPPKRLTREAMRNYLKERGDQTVLILHAKVAQKSYGNEKRFFCPPPCVYLMGSGWKKKKEQMERDGCSEQESQPCAFIGIGNSDQEMQQLNLEGKNYCTAKTLYISDSDKRKHFMLSVKMFYGNSDDIGVFLSKRIKVISKPSKKKQSLKNADLCIASGTKVALFNRLRSQTVSTRYLHVEGGNFHASSQQWGAFFIHLLDDDESEGEEFTVRDGYIHYGQTVKLVCSVTGMALPRLIIRKVDKQTALLDADDPVSQLHKCAFYLKDTERMYLCLSQERIIQFQATPCPKEPNKEMINDGASWTIISTDKAEYTFYEGMGPVLAPVTPVPVVESLQLNGGGDVAMLELTGQNFTPNLRVWFGDVEAETMYRCGESMLCVVPDISAFREGWRWVRQPVQVPVTLVRNDGIIYSTSLTFTYTPEPGPRPHCSAAGAILRANSSQVPPNESNTNSEGSYTNASTNSTSVTSSTATVVS

SEQ ID NO: 8250 - protein, 303 aa, Homo sapiens
MTRTFPEDGGGNRGPEPVPELGAPSPTKRKDRSDEKSKDRSKDKGATKESSEKDRGRDKTRKRRSASSGSSSTRSRSSSTSSSGSSTSTGSSSGSSSSSASSRSGSSSTSRSSSSSSSSGSPSPSRRRHDNRRRSRSKSKPPKRDEKERKRRSPSPKPTKVHIGRLTRNVTKDHIMEIFSTYGKIKMIDMPVERMHPHLSKGYAYVEFENPDEAEKALKHMDGGQIDGQEITATAVLAPWPRPPPRRFSPPRRMLPPPPMWRRSPPRMRRRSRSPRRRSPVRRRSRSPGRRRHRSRSSSNSSR

SEQ ID NO: 8251 - protein, 282 aa, Homo sapiens
MAPSPTKRKDRSDEKSKDRSKDKGATKESSEKDRGRDKTRKRRSASSGSSSTRSRSSSTSSSGSSTSTGSSSGSSSSSASSRSGSSSTSRSSSSSSSSGSPSPSRRRHDNRRRSRSKSKPPKRDEKERKRRSPSPKPTKVHIGRLTRNVTKDHIMEIFSTYGKIKMIDMPVERMHPHLSKGYAYVEFENPDEAEKALKHMDGGQIDGQEITATAVLAPWPRPPPRRFSPPRRMLPPPPMWRRSPPRMRRRSRSPRRRSPVRRRSRSPGRRRHRSRSSSNSSR

SEQ ID NO: 8252 - protein, 133 aa, Homo sapiens
MAPSPTKRKDRSDEKSKDRSKDKGATKESSEKDRGRDKTRKRRSASSGSSSTRSRSSSTSSSGSSTSTGSSSGSSSSSASSRSGSSSTSRSSSSSSSSGSPNPNHLKEMKRRGKGGAHLLSPPKCTLGDSPGM

SEQ ID NO: 8253 - protein, 188 aa, Homo sapiens
ISSSGSPSPSRRRHDNRRRSRSKSKPPKRDEKERKRRSPSPKPTKVHIGRLTRNVTKDHIMEIFSTYGKIKMIDMPVERMHPHLSKGYAYVEFENPDEAEKALKHMDGGQIDGQEITATAVLAPWPRPPPRRFSPPRRMLPPPPMWRRSPPRMRRRSRSPRRRSPVRRRSRSPGRRRHRSRSSSNSSR

SEQ ID NO: 8254 - protein, 226 aa, Homo sapiens
MIAYARIEGDMIVCAAYAHELPKYGVKVGLTNYAAAYCTGLLLARRLLNRFGMDKIYEGQVEVTGDEYNVESIDGQPGAFTCYLDAGLARTTTGNKVFGALKGAVDGGLSIPHSTKRFPGYDSESKEFNAEVHRKHIMGQNVADYMRYLMEEDEDAYKKQFSQYIKNSVTPDMMEEMYKKAHAAIRENPVYEKKPKKEVKKKRWNRPKMSLAQKKDRVAQKKASFL

SEQ ID NO: 8255 - protein, 61 aa, Homo sapiens
MTLRITTRKTPCGEGSKTWDRFQMRIHKRLIDLHSPSEIVKQITSISIEPGVEVEVTIADA

SEQ ID NO: 8256 - protein, 738 aa, Homo sapiens
MVRVLRSMCLPQLCSHILSVCSGTTSDRKKTYDEKKTYDQQKFDSERADGTISSEIKSARGSHHLSIYAENSLKSDGYHKRTDRKSRIIAKNVSTSKPEFEFTTLDFPELQGAENNMSEIQKQPKWGPVHSVSTDISLLREVVKPAAVLSKGEIVVKNNPNESVTANAATNSPSCTRELSWTPMGYVVRQTLSTELSAAPKNVTSMINLKTIASSADPKNVSIPSSEALSSDPSYNKEKHIIHPTQKSKASQGSDLEQNEASRKNKKKKEKSTSKYEVLTVQEPPRIEDAEEFPNLAVASERRDRIETPKFQSKQQPQDNFKNNVKKSQLPVQLDLGGMLTALEKKQHSQHAKQSSKPVVVSVGAVPVLSKECASGERGRRMSQMKTPHNPLDSSAPLMKKGKQREIPKAKKPTSLKKIILKERQERKQRLQENAVSPAFTSDDTQDGESGGDDQFPEQAELSGPEGMDELISTPSVEDKSEEPPGTELQRDTEASHLAPNHTTFPKIHSRRFRDYCSQMLSKEVDACVTDLLKELVRFQDRMYQKDPVKAKTKRRLVLGLREVLKHLKLKKLKCVIISPNCEKIQSKGGLDDTLHTIIDYACEQNIPFVFALNRKALGRSLNKAVPVSVVGIFSYDGAQDQFHKMVELTVAARQAYKTMLENVQQELVGEPRPQAPPSLPTQGPSCPAEDGPPALKEKEEPHYIEIWKKHLEAYSGCTLELEESLEASTSQMMNLNL

SEQ ID NO: 8257 - protein, 453 aa, Homo sapiens
MGPREEIVYLPCIYRNTGTEAPDYLATVDVDPKSPQYCQVIHRLPMPNLKDELHHSGWNTCSSCFGDSTKSRTKLVLPSLISSRIYVVDVGSEPRAPKLHKVIEPKDIHAKCELAFLHTSHCLASGEVMISSLGDVKGNGKGGFVLLDGETFEVKGTWERPGGAAPLGYDFWYQPRHNVMISTEWAAPNVLRDGFNPADVEAGLYGSHLYVWDWQRHEIVQTLSLKDGLIPLEIRFLHNPDAAQGFVGCALSSTIQRFYKNEGGTWSVEKVIQVPPKKVKGWLLPEMPGLITDILLSLDDRFLYFSNWLHGDLRQYDISDPQRPRLTGQLFLGGSIVKGGPVQVLEDEELKSQPEPLVVKGKRVAGGPQMIQLSLDGKRLYITTSLYSAWDKQFYPDLIREGSVMLQVDVDTVKGGLKLNPNFLVDFGKEPLGPALAHELRYPGGDCSSDIWI

SEQ ID NO: 8258 - protein, 104 aa, Homo sapiens
MGPREEIVYLPCIYRNTGTEAPDYLATVDVDPKSPQYCQVIHRLPMPNLKDELHHSGWNTCSSCFGDSTKSRTKLVLPSLISSRIYVVDVGSEPRAPKLHKACH

SEQ ID NO: 8259 - protein, 116 aa, Homo sapiens
MAVAVGRPSNEELRNLSLSGHVGFDSLPDQLVNKSTSQGFCFNILCVGETGIGKSTLMDTLFNTKFESDPATHNEPGVRLKARSYELQESNVRLKLTIVDTVGFGDQINKDDSYKP

SEQ ID NO: 8260 - protein, 57 aa, Homo sapiens
MAEPDLDFLRNLFSQTLSLGSQKERLLDELTLEGVARYMQSERSATVSLLRQPGLLP

SEQ ID NO: 8261 - protein, 357 aa, Homo sapiens
MAEPDLDFLRNLFSQTLSLGSQKERLLDELTLEGVARYMQSERCRRVICLVGAGISTSAGIPDFRSPSTGLYDNLEKYHLPYPEAIFEISYFKKHPEPFFALAKELYPGQFKPTICHYFMRLLKDKGLLLRCYTQNIDTLERIAGLEQEDLVEAHGTFYTSHCVSASCRHEYPLSWMKEKIFSEVTPKCEDCQSLVKPDIVFFGESLPARFFSCMQSDFLKVDLLLVMGTSLQVQPFASLISKAPLSTPRLLINKEKAGQSDPFLGMIMGLGGGMDFDSKKAYRDVAWLGECDQGCLALAELLGWKKELEDLVRREHASIDAQSGAGVPNPSTSASPKKSPPPAKDEARTTEREKPQ

SEQ ID NO: 8262 - protein, 239 aa, Homo sapiens
MAEPDLDFLRNLFSQTLSLGSQKERLLDELTLEGVARYMQSERCRRVICLVGAGISTSAGIPDFRSPSTGLYDNLEKYHLPYPEAIFEISYFKKHPEPFFALAKELYPGQFKPTICHYFMRLLKDKGLLLRCYTQNIDTLERIAGLEQEDLVEAHGTFYTSHCVSASCRHEYPLSWMKEKIFSEVTPKCEDCQSLVKPDIVFFGESLPARFFSCMQSDFLKVDLLLVMGTSLQGRGLAG

SEQ ID NO: 8263 - protein, 44 aa, Homo sapiens
MAEPDLDFLRNLFSQTLSLGSQKERLLDELTLEGVARYMQSERC

SEQ ID NO: 8264 - protein, 116 aa, Homo sapiens
MAEPDLDFLRNLFSQTLSLGSQKERLLDELTLEGVARYMQSERCRRVICLVGAGISTSAGIPDFRSPSTGLYDNLEKYHLPYPEAIFEISYFKKHPEPFFALAKELYPGQFKFPHL

SEQ ID NO: 8265 - protein, 85 aa, Homo sapiens
MDRPGFVAALVVACLIRVPSEVVKQRAQVSASTRTFQIFSNILYEEGIQGLYRGYKSTVLREIPFSLVQFPLWESLKGWKPYNCF

SEQ ID NO: 8266 - protein, 185 aa, Homo sapiens
MDRPGFVAALVVACLIRVPSEVVKQRAQVSASTRTFQIFSNILYEEGIQGLYRGYKSTVLREIPFSLVQFPLWESLKALWSWRQDHVVDSWQSAVCGAFAGGFAAAVTTPLDVAKTRITLAKAGSSTADGNVLSVLHGVWRSQGLAGLFAGVFPRMAAISLGGFIFLGAYDRTHSLLLEVGRKSP

SEQ ID NO: 8267 - protein, 303 aa, Homo sapiens
MSKRPSYAPPPTPAPATQMPSTPGFVGYNPYSHLAYNNYRLGGNPGTNSRVTASSGITIPKPPKPPDKPLMPYMRYSRKVWDQVKASNPDLKLWEIGKIIGGMWRDLTDEEKQEYLNEYEAEKIEYNESMKAYHNSPAYLAYINAKSRAEAALEEESRQRQSRMEKGEPYMSIQPAEDPDDYDDGFSMKHTATARFQRNHRLISEILSESVVPDVRSVVTTARMQVLKRQVQSLMVHQRKLEAELLQIEERHQEKKRKFLESTDSFNNELKRLCGLKVEVDMEKIAAEIAQAEEQARKRQEER

SEQ ID NO: 8268 - protein, 1233 aa, Homo sapiens
MGFLKLIEIENFKSYKGRQIIGPFQRFTAIIGPNGSGKSNLMDAISFVLGEKTSNLRVKTLRDLIHGAPVGKPAANRAFVSMVYSEEGAEDRTFARVIVGGSSEYKINNKVVQLHEYSEELEKLGILIKARNFLVFQGAVESIAMKNPKERTALFEEISRSGELAQEYDKRKKEMVKAEEDTQFNYHRKKNIAAERKEAKQEKEEADRYQRLKDEVVRAQVQLQLFKLYHNEVEIEKLNKELASKNKEIEKDKKRMDKVEDELKEKKKELGKMMREQQQIEKEIKEKDSELNQKRPQYIKAKENTSHKIKKLEAAKKSLQNAQKHYKKRKGDMDELEKEMLSVEKARQEFEERMEEESQSQGRDLTLEENQVKKYHRLKEEASKRAATLAQELEKFNRDQKADQDRLDLEERKKVETEAKIKQKLREIEENQKRIEKLEEYITTSKQSLEEQKKLEGELTEEVEMAKRRIDEINKELNQVMEQLGDARIDRQESSRQQRKAEIMESIKRLYPGSVYGRLIDLCQPTQKKYQIAVTKVLGKNMDAIIVDSEKTGRDCIQYIKEQRGEPETFLPLDYLEVKPTDEKLRELKGAKLVIDVIRYEPPHIKKALQYACGNALVCDNVEDARRIAFGGHQRHKTVALDGTLFQKSGVISGGASDLKAKARRWDEKAVDKLKEKKERLTEELKEQMKAKRKEAELRQVQSQAHGLQMRLKYSQSDLEQTKTRHLALNLQEKSKLESELANFGPRINDIKRIIQSREREMKDLKEKMNQVEDEVFEEFCREIGVRNIREFEEEKVKRQNEIAKKRLEFENQKTRLGIQLDFEKNQLKEDQDKVHMWEQTVKKDENEIEKLKKEEQRHMKIIDETMAQLQDLKNQHLAKKSEVNDKNHEMEEIRKKLGGANKEMTHLQKEVTAIETKLEQKRSDRHNLLQACKMQDIKLPLSKGTMDDISQEEGSSQGEDSVSGSQRISSIYAREALIEIDYGDLCEDLKDAQAEEEIKQEMNTLQQKLNEQQSVLQRIAAPNMKAMEKLESVRDKFQETSDEFEAARKRAKKAKQAFEQIKKERFDRFNACFESVATNIDEIYKALSRNSSAQAFLGPENPEEPYLDGINYNCVAPGKRFRPMDNLSGGEKTVAALALLFAIHSYKPAPFFVLDEIDAALDNTNIGKVANYIKEQSTCNFQAIVISLKEEFYTKAESLIGVYPEQGDCVISKVLTFDLTKYPDANPNPNEQ

SEQ ID NO: 8269 - protein, 361 aa, Homo sapiens
MSRRAPGSRLSSGGGGGGTKYPRSWNDWQPRTDSASADPDNLKYSSSRDRGGSSSYGLQPSNSAVVSRQRHDDTRVHADIQNDEKGGYSVNGGSGENTYGRKSLGQELRVNNVTSPEFTSVQHGSRALATKDMRKSQERSMSYSDESRLSNLLRRITREDDRDRRLATVKQLKEFIQQPENKLVLVKQLDNILAAVHDVLNESSKLLQELRQEGACCLGLLCASLSYEAEKIFKWIFSKFSSSAKDEVKLLYLCATYKALETVGEKKAFSSVMQLVMTSLQSILENVDTPELLCKCVKCILLVARCYPHIFSTNFRDTVDILVGWHIDHTQKPSLTQQVSGWLQSLEPFWVADLAFSTTLL

SEQ ID NO: 8270 - protein, 102 aa, Homo sapiens
MTFFTHLWDGDPVSQVAGSPTEIPFSSKQEDMSELLDEILVQEILDLNKTTPSEMPSTASTLSTPLHAGIDENYQAGGSENYHELLENLQFSPGIEVKISND

SEQ ID NO: 8271 - protein, 115 aa, Homo sapiens
MSEETATSDNDYSNSILNSSAVPHSSALKPTLVVLECMLKKDLIYNKVTPTFHHWKIDDKKFGLTFQSPADARAFDRGIRRAIEDISQGCPESKNEAEGADDLQANEEDSSSSLV

SEQ ID NO: 8272 - protein, 445 aa, Homo sapiens
MVLADLGRKITSALRSLSNATIINEELVDPGVKAWTPTKGKQNVIMFVGLQGSGKTTTCSKLAYYYQRKGWKTCLICADTFRAGAFDQLKQNATKARIPFYGSYTEMDPVIIASEGVEKFKNENFEIIIVDTSGRHKQEDSLFEEMLQVANAIQPDNIVYVMDASIGQACEAQAKAFKDKVDVASVIVTKLDGHAKGGGALSAVAATKSPIIFIGTGEHIDDFEPFKTQPFISKLLGMGDIEGLIDKVNELKLDDNEALIEKLKHGQFTLRDMYEQFQNIMKMGPFSQILGMIPGFGTDFMSKGNEQESMARLKKLMTIMDSMNDQELDSTDGAKVFSKQPGRIQRVARGSGVSTRDVQELLTQYTKFAQMVKKMGGIKGLFKGGDMSKNVSQSQMAKLNQQMAKMMDPRVLHHMGGMAGLQSMMRQFQQGAAGNMKGMMGFNNM

SEQ ID NO: 8273 - protein, 171 aa, Homo sapiens
MSSRKVLAIQARKRRPKREKHPKKPEPQQKAPLVPPPPPPPPPPPPPLPDPTPPEPEEEILGSDDEEQEDPADYCKGGYHPVKIGDLFNGRYHVIRKLGWGHFSTVWLCWDMQGKRFVAMKVVKSAQHYTETALDEIKLLKCVRESDPSDPNKDMVVQLIDDFKISGMNGI

SEQ ID NO: 8274 - protein, 82 aa, Homo sapiens
MEKYHVLEMIGEGSFGRVYKGRRKYSAQVVVVTDYAEGELFQILEDDGKLPEDQVQAIAAQLVSALYYLHSHRILHRDMKPQ

SEQ ID NO: 8275 - protein, 163 aa, Homo sapiens
MSFLVSKPERIRRWVSEKFIVEGLRDLELFGGKGFEDLMTVNLARYKPTGEYVTVRRINLEACSNEMVTFLQGELHVSKLFNHPNIVPYRATFIADNELWVVTSFMAYGSAKDLICTHFMDGMNELAIAYILQGVLKALDYIHHMGYVHRSVKASHILISVDG

SEQ ID NO: 8276 - protein, 92 aa, Homo sapiens
MSFLVSKPERIRRWVSEKFIVEGLRDLELFGGKGFEDLMTVNLARYKPTGEYVTVRRINLEACSNEMVTFLQGELHVSKLFNHPNIVPYRAT

SEQ ID NO: 8277 - protein, 187 aa, Homo sapiens
MSFLVSKPERIRRWVSEKFIVEGLRDLELFGGKGFEDLMTVNLARYKPTGEYVTVRRINLEACSNEMVTFLQGELHVSKLFNHPNIVPYRATFIADNELWVVTSFMAYGSAKDLICTHFMDGMNELAIAYILQGVLKALDYIHHMGYVHRISRVMMPSLTSTVWESQPVNWPTAMSPLRICLPPRCC

SEQ ID NO: 8278 - protein, 359 aa, Homo sapiens
MSFLVSKPERIRRWVSEKFIVEGLRDLELFGGKGFEDLMTVNLARYKPTGEYVTVRRINLEACSNEMVTFLQGELHVSKLFNHPNIVPYRATFIADNELWVVTSFMAYGSAKDLICTHFMDGMNELAIAYILQGVLKALDYIHHMGYVHRSVKASHILISVDGKVYLSGLRSNLSMISHGQRQRVVHDFPKYSVKVLPWLSPEVLQQNLQGYDAKSDIYSVGITACELANGHVPFKDMPATQMLLEKLNGTVPCLLDTSTIPAEELTMSPSRSVANSGLSDSLTTSTPRPSNGDSPSHPYHRTFSPHFHHFVEQCLQRNPDARSSDVPQRLCPNCFVLSPPSPILRAASLRTTVESLAW

SEQ ID NO: 8279 - protein, 56 aa, Homo sapiens
MSFLRWVSEKFIVEGLRDLELFGGKGFEDLMTVNLARYKPTGEYVTVRRINLEACS

SEQ ID NO: 8280 - protein, 299 aa, Homo sapiens
MSFLVSKPERIRRWVSEKFIVEGLRDLELFGGKGFEDLMTVNLARYKPTGEYVTVRRINLEACSNEMVTFLQGELHVSKLFNHPNIVPYRATFIADNELWVVTSFMAYGSAKDLICTHFMDGMNELAIAYILQGVLKALDYIHHMGYVHRSVKASHILISVDGKVYLSGLRSNLSMISHGQRQRVVHDFPKYSVKVLPWLSPEVLQQNLQGYDAKSDIYSVGITACELANGHVPFKDMPATQMLLEKLNGTVPCLLDTSTIPAEELTMSPSRSVANSGLSDSLTTSTPRPSNGPVPAPS

SEQ ID NO: 8281 - protein, 387 aa, Homo sapiens
MSFLVSKPERIRRWVSEKFIVEGLRDLELFGGKGFEDLMTVNLARYKPTGEYVTVRRINLEACSNEMVTFLQGELHVSKLFNHPNIVPYRATFIADNELWVVTSFMAYGSAKDLICTHFMDGMNELAIAYILQGVLKALDYIHHMGYVHRSVKASHILISVDGKVYLSGLRSNLSMISHGQRQRVVHDFPKYSVKVLPWLSPEVLQQNLQGYDAKSDIYSVGITACELANGHVPFKDMPATQMLLEKLNGTVPCLLDTSTIPAEELTMSPSRSVANSGLSDSLTTSTPRPSNGDSPSHPYHRTFSPHFHHFVEQCLQRNPDARPSASTLLNHSFFKQIKRRASEALPELLRPVTPITNFEGSQSQDHSGIFGLVTNLEELEVDDWEF

SEQ ID NO: 8282 - protein, 379 aa, Homo sapiens
MSFLRWVSEKFIVEGLRDLELFGGKGFEDLMTVNLARYKPTGEYVTVRRINLEACSNEMVTFLQGELHVSKLFNHPNIVPYRATFIADNELWVVTSFMAYGSAKDLICTHFMDGMNELAIAYILQGVLKALDYIHHMGYVHRSVKASHILISVDGKVYLSGLRSNLSMISHGQRQRVVHDFPKYSVKVLPWLSPEVLQQNLQGYDAKSDIYSVGITACELANGHVPFKDMPATQMLLEKLNGTVPCLLDTSTIPAEELTMSPSRSVANSGLSDSLTTSTPRPSNGDSPSHPYHRTFSPHFHHFVEQCLQRNPDARPSASTLLNHSFFKQIKRRASEALPELLRPVTPITNFEGSQSQDHSGIFGLVTNLEELEVDDWEF

SEQ ID NO: 8283 - protein, 248 aa, Homo sapiens
MSFLVSKPERIRRWVSEKFIVEGLRDLELFGGKGFEDLMTVNLARYKPTGEYVTVRRINLEACSNEMVTFLQGELHVSKLFNHPNIVPYRATFIADNELWVVTSFMAYGSAKDLICTHFMDGMNELAIAYILQGVLKALDYIHHMGYVHRSVKASHILISVDGKVYLSGLRSNLSMISHGQRQRVVHDFPKYSVKVLPWLSPEVLQQGYDAKSDIYSVGITACELANGHVPFKDMPATQGEDSTVKGI

SEQ ID NO: 8284 - protein, 75 aa, Homo sapiens
MSDQEAKPSTEDLGDKKEGEYIKLKVIGQGVPMNSLRFLFEGQRIADNHTPKELGMEEEDVIEVYQEQTGGHSTV

SEQ ID NO: 8285 - protein, 69 aa, Homo sapiens
MRPDICLYGTQQHHIQGFSHSAFTFGIESHISQSNINGALVPPAALISIIQKGLQYVEAEVSINEDGTL

SEQ ID NO: 8286 - protein, 117 aa, Homo sapiens
MRPDICLYGTQQHHIQGFSHSAFTFGIESHISQSNINGALVPPAALISIIQKGLQYVEAEVSINEDGTLFDGRPIESLSLIDAVMPDVVQTRQQAYRDKLAQQQAAAAAAAAAAASQ

SEQ ID NO: 8287 - protein, 128 aa, Homo sapiens
MRPDICLYGTQQHHIQGFSHSAFTFGIESHISQSNINGALVPPAALISIIQKGLQYVEAEVSINEDGTLFDGRPIESLSLIDAVMPDVVQTRQQAYRDKLAQQQAAAAAAAAAAASQQGSAKNGENTA

SEQ ID NO: 8288 - protein, 78 aa, Homo sapiens
MRPDICLYGTQQHHIQGFSHSAFTFGIESHISQSNINGALVPPAALISIIQKGLQYVEAEVSINEDGTLFDGRPIESL

SEQ ID NO: 8289 - protein, 1041 aa, Homo sapiens
MENMFLQSSMLTCIFLLISGSCELCAEENFSRSYPCDEKKQNDSVIAECSNRRLQEVPQTVGKYVTELDLSDNFITHITNESFQGLQNLTKINLNHNPNVQHQNGNPGIQSNGLNITDGAFLNLKNLRELLLEDNQLPQIPSGLPESLTELSLIQNNIYNITKEGISRLINLKNLYLAWNCYFNKVCEKTNIEDGVFETLTNLELLSLSFNSLSHVPPKLPSSLRKLFLSNTQIKYISEEDFKGLINLTLLDLSGNCPRCFNAPFPCVPCDGGASINIDRFAFQNLTQLRYLNLSSTSLRKINAAWFKNMPHLKVLDLEFNYLVGEIASGAFLTMLPRLEILDLSFNYIKGSYPQHINISRNFSKLLSLRALHLRGYVFQELREDDFQPLMQLPNLSTINLGINFIKQIDFKLFQNFSNLEIIYLSENRISPLVKDTRQSYANSSSFQRHIRKRRSTDFEFDPHSNFYHFTRPLIKPQCAAYGKALDLSLNSIFFIGPNQFENLPDIACLNLSANSNAQVLSGTEFSAIPHVKYLDLTNNRLDFDNASALTELSDLEVLDLSYNSHYFRIAGVTHHLEFIQNFTNLKVLNLSHNNIYTLTDKYNLESKSLVELVFSGNRLDILWNDDDNRYISIFKGLKNLTRLDLSLNRLKHIPNEAFLNLPASLTELHINDNMLKFFNWTLLQQFPRLELLDLRGNKLLFLTDSLSDFTSSLRTLLLSHNRISHLPSGFLSEVSSLKHLDLSSNLLKTINKSALETKTTTKLSMLELHGNPFECTCDIGDFRRWMDEHLNVKIPRLVDVICASPGDQRGKSIVSLELTTCVSDVTAVILFFFTFFITTMVMLAALAHHLFYWDVWFIYNVCLAKVKGYRSLSTSQTFYDAYISYDTKDASVTDWVINELRYHLEESRDKNVLLCLEERDWDPGLAIIDNLMQSINQSKKTVFVLTKKYAKSWNFKTAFYLALQRLMDENMDVIIFILLEPVLQHSQYLRLRQRICKSSILQWPDNPKAEGLFWQTLRNVVLTENDSRYNNMYVDSIKQY

SEQ ID NO: 8290 - protein, 178 aa, Homo sapiens
MKTVAGALLSLVMGQPSEGRPELTPIAIMAGRLLVQRLFGGSSDLMDYDNVPTTVFTPLEYGCVGLSEEEAVARHGQEHVEVYHAHYKPLEFTVAGRDASQCYVKMVCLREPPQLVLGLHFLGPNAGEVTQGFALGIKCGASYAQVMRTVGIHPTCSEEVVKLRISKRSGLDPTVTGC

SEQ ID NO: 8291 - protein, 872 aa, Homo sapiens
MATACKRSGEPQSDDIEASRMKRAAAKHLIERYYHQLTEGCGNEACTNEFCASCPTFLRMDNNAAAIKALELYKINAKLCDPHPSKKGASSAYLENSKGAPNNSCSEIKMNKKGARIDFKDVTYLTEEKVYEILELCREREDYSPLIRVIGRVFSSAEALVQSFRKVKQHTKEELKSLQAKDEDKDEDEKEKAACSAAAMEEDSEASSSRIGDSSQGDNNLQKLGPDDVSVDIDAIRRVYTRLLSNEKIETAFLNALVYLSPNVECDLTYHNVYSRDPNYLNLFIIVMENRNLHSPEYLEMALPLFCKAMSKLPLAAQGKLIRLWSKYNADQIRRMMETFQQLITYKVISNEFNSRNLVNDDDAIVAASKCLKMVYYANVVGGEVDTNHNEEDDEEPIPESSELTLQELLGEERRNKKGPRVDPLETELGVKTLDCRKPLIPFEEFINEPLNEVLEMDKDYTFFKVETENKFSFMTCPFILNAVTKNLGLYYDNRIRMYSERRITVLYSLVQGQQLNPYLRLKVRRDHIIDDALVRLEMIAMENPADLKKQLYVEFEGEQGVDEGGVSKEFFQLVVEEIFNPDIGMFTYDESTKLFWFNPSSFETEGQFTLIGIVLGLAIYNNCILDVHFPMVVYRKLMGKKGTFRDLGDSHPVLYQSLKDLLEYEGNVEDDMMITFQISQTDLFGNPMMYDLKENGDKIPITNENRKEFVNLYSDYILNKSVEKQFKAFRRGFHMVTNESPLKYLFRPEEIELLICGSRNLDFQALEETTEYDGGYTRDSVLIREFWEIVHSFTDEQKRLFLQFTTGTDRAPVGGLGKLKMIIAKNGPDTERLPTSHTCFNVLLLPEYSSKEKLKERLLKAITYAKGFGML

SEQ ID NO: 8292 - protein, 872 aa, Homo sapiens; identical to SEQ ID NO: 8291

SEQ ID NO: 8293 - protein, 66 aa, Homo sapiens
ILSVPESTPFTAVLKFAAEEFKVPAATSAIITNDGIGINPAQTAGNVFLKHGSELRIIPRDRVGSC

SEQ ID NO: 8294 - protein, 171 aa, Homo sapiens
MLSRPEGGLAALPGTSYSPQENSHNHSALHSSNSHSSNPSNNPSKTSDAPYDSADDWSEHISSSGKKYYYNCRTEVSQWEKPKEWLEREQRQKEANKMAVNSFPKDRDYRREVMQATATSGFASGMEDKHSSDASSLLPQNILSQTSRHNDRDYRLPRAETHSSSTPVQHP

SEQ ID NO: 8295 - protein, 738 aa, Homo sapiens
MLVRVVLSLTPSFPEPSALYTACKMVRWLSAKLGPTVASRHVARNLLRLLTSCYVGPTRQQFTVSSGESPPLSAGNIYQKRPVLGDIVSGPVLSCLLHIARLYGEPVLTYQYLPYISYLVAPGSASGPSRLNSRKEAGLLAAVTLTQKIIVYLSDTTLMDILPRISHEVLLPVLSFLTSLVTGFPSGAQARTILCVKTISLIALICLRIGQEMVQQHLSEPVATFFQVFSQLHELRQQDLKLDPAGRGEGQLPQVVFSDGQQRPVDPALLDELQKVFTLEMAYTIYVPFSCLLGDIIRKIIPNHELVGELAALYLESISPSSRNPASVEPTMPGTGPEWDPHGGGCPQDDGHSGTFGSVLVGNRIQIPNDSRPENPGPLGPISGVGGGGLGSGSDDNALKQELPRSVHGLSGNWLAYWQYEIGVSQQDAHFHFHQIRLQSFPGHSGAVKCVAPLSSEDFFLSGSKDRTVRLWPLYNYGDGTSETAPRLVYTQHRKSVFFVGQLEAPQHVVSCDGAVHVWDPFTGKTLRTVEPLDSRVPLTAVAVMPAPHTSITMASSDSTLRFVDCRKPGLQHEFRLGGGLNPGLVRALAISPSGRSVVAGFSSGFMVLLDTRTGLVLRGWPAHEGDILQIKAVEGSVLVSSSSDHSLTVWKELEQKPTHHYKSASDPIHTFDLYGSEVVTGTVSNKIGVCSLLEPPSQATTKLSSENFRGTLTSLALLPTKRHLLLGSDNGVIRLLA

SEQ ID NO: 8296 - protein, 256 aa, Homo sapiens
MFSLSSTVQPQVTVPLSHLINAFHTPKNTSVSLSGVSVSQNQHRDVVPEHEAPSSEPSLNLRDLGLSELKIGQIDQLVENLLPGFCKGKNISSHWHTSHVSAQSFFENKYGNLDIFSTLRSSCLYRHHSRALQSICSDLQYWPVFIQSRGFKTLKSRTRRLQSTSERLAETQNIAPSFVKGFLLRDRGSDVESLDKLMKTKNIPEAHQDAFKTGFAEGFLKAQALTQKTNDSLRRTRLILFVLLLFGIYGLLKNPF

SEQ ID NO: 8297 - protein, 273 aa, Homo sapiens
MGDLELLLPGEAEVLVPTLVEELIAVEMWKQKVFPVFCRVEDFKPQNTFPIYMVVHHEASIINLLETVFFHKEVCESAEDTVLDLVDYCHRKLTLLVAQSGCGGPPEGEGSQDSNPMQELQKQAELMEFEIALKALSVLRYITDCVDSLSLSTLSRMLSTHNLPCLLVELLEHSPWSRREGGKLQQFEGSRWHTVAPSEQQKLSKLDGQVWIALYNLLLSPEAQARYCLTSFAKGRLLKLRAFLTDTLLDQLPNLAHLQSFLAHLTLTETQPP
